United States Patent Application Publication US 2011/0214205 A1 - sequence listing, part 27

SEQ ID NO: 131790 - protein, 130 aa, Setaria italica
  Transcript Sequence Number=SeqID_65816
  Gene Ontology: Mol. function=structural constituent of ribosome; Cellular component=ribonucleoprotein complex; Biological process =translation
  Homolog annotation: Hit_ID=P49397; Match level="QueryCoverage=100%, HitCoverage=48%, E-value=1e-62, Identity=89%"; Hit description=40S ribosomal protein S3a
  Pfam annotation: Domain name=Ribosomal_S3Ae; Domain location=1-127; Score=151.3; E_value=2.9e-42; Accession=PF01015.10; Description =Ribosomal S3Ae family
KVSLADLQSDEDQAYRKIRLRAEDVQGKNVLTNFWGMDFTTDKLRSLVKKWQTLIEAHVDVKTTDNYMLRLFCIGFTKRRPNQVKRTCYAQASQIRQIRRKMVEIMTNQASTCDLKELVAFSTSLPMTSG

SEQ ID NO: 131791 - protein, 57 aa, Setaria italica
  misc_feature (48)..(48): Xaa can be any naturally occurring amino acid
  Transcript Sequence Number=SeqID_65817
  Gene Ontology: Mol. function=structural constituent of ribosome; Cellular component=ribonucleoprotein complex; Biological process =translation
  Homolog annotation: Hit_ID=P49397; Match level="QueryCoverage=89%, HitCoverage=19%, E-value=6e-18, Identity=88%"; Hit description=40S ribosomal protein S3a
HHFFVKIRRKMVEIMTNQASTCDLKELVSKFIPEVIGKEVEKATSSIXFPLQNVFIP

SEQ ID NO: 131792 - protein, 78 aa, Setaria italica
  Transcript Sequence Number=SeqID_65818
  Gene Ontology: Mol. function=structural constituent of ribosome; Cellular component=ribonucleoprotein complex; Biological process =translation
  Homolog annotation: Hit_ID=P49397; Match level="QueryCoverage=98%, HitCoverage=29%, E-value=2e-33, Identity=88%"; Hit description=40S ribosomal protein S3a
  Pfam annotation: Domain name=Ribosomal_S3Ae; Domain location=1-78; Score=-52.8; E_value=0.0042; Accession=PF01015.10; Description =Ribosomal S3Ae family
EHVVVRCLDINMLRLFCIGFTKRRPNQVKRTCYAQASQIRQIRRKMVEIMTNQASTCDLKELVSKFIPEVIGKEVEKA

SEQ ID NO: 131793 - protein, 52 aa, Setaria italica
  Transcript Sequence Number=SeqID_65819
MISYENLNYTSGKPSRYSSSFHTKSCSHGTGLDKSVAPSRYQTLTGKFISPT

SEQ ID NO: 131794 - protein, 30 aa, Setaria italica
  Transcript Sequence Number=SeqID_65820
DYKEDVGTKVERPAEADEANREGTRKVRLD

SEQ ID NO: 131795 - protein, 40 aa, Setaria italica
  Transcript Sequence Number=SeqID_65821
GFGKMNITASNDLNEETIDALNKQVIYLVPIQKIKWLVMS

SEQ ID NO: 131796 - protein, 155 aa, Setaria italica
  Transcript Sequence Number=SeqID_65822
  Gene Ontology: Mol. function=nucleoside-triphosphatase activity; Cellular component=cytoplasm; Biological process=transport
  Homolog annotation: Hit_ID=B9GRP1; Match level="QueryCoverage=92%, HitCoverage=52%, E-value=9e-71, Identity=86%"; Hit description=ABC transporter family protein
  Pfam annotation: Domain name=ABC_tran; Domain location=11-154; Score=- 39.0; E_value=0.0037; Accession=PF00005.19; Description=ABC transporter
FARFNLRIAPGSRCLLVGANGSGKTTLLKILAGKHMVGGRDVVRVLNGSAFHDTQLVCNGELSYLGGSWSQTIGSAGDVPLQGDFSAEHMIFGVDGVDPVRREKLVDLLDIDLQWRMHKVSDGQRRRVQICMGLLHPYKVMFLFPTYCGFCCLGS

SEQ ID NO: 131797 - protein, 84 aa, Setaria italica
  Transcript Sequence Number=SeqID_65823
YGKYSPGINFLVALLSKLGYSQELSEAHYGAESNGHTRVTFILEIIQLFWALAPSSSFLSCSEKSSLTSSSSQSSSHCWTASLP

SEQ ID NO: 131798 - protein, 46 aa, Setaria italica
  Transcript Sequence Number=SeqID_65824
  Pfam annotation: Domain name=DSS1_SEM1; Domain location=2-41; Score =30.2; E_value=8.3e-06; Accession=PF05160.5; Description=DSS1SEM1 family
YQEWDDKEEGNEAVQQWEDDWDDDDVNDDFSLQLRKELEGASAQKS

SEQ ID NO: 131799 - protein, 76 aa, Setaria italica
  misc_feature (55)..(55): Xaa can be any naturally occurring amino acid
  misc_feature (58)..(58): Xaa can be any naturally occurring amino acid
  Transcript Sequence Number=SeqID_65825
  Gene Ontology: Mol. function=catalytic activity; Biological process =metabolic process
  Homolog annotation: Hit_ID=Q6RBX9; Match level="QueryCoverage=96%, HitCoverage=11%, E-value=2e-11, Identity=46%"; Hit description =Glossy1 protein
GGTLNGKSWELQEKNSAGSDEIPGFVFLAHVVDVMSSMHSRMSSRYRASLPYRTXPFXVLMWPVAFVFMLMMWAGP

SEQ ID NO: 131800 - protein, 79 aa, Setaria italica
  Transcript Sequence Number=SeqID_65826
LCFQLYIFILQFTKKKAVFLSGAFTFMFHLFIYFGSHLVPLVHICSSFLRKFIYMFLLLNTLSIPNCKSFLAFLDMVCI

SEQ ID NO: 131801 - protein, 126 aa, Setaria italica
  misc_feature (17)..(17): Xaa can be any naturally occurring amino acid
  Transcript Sequence Number=SeqID_65827
  Gene Ontology: Mol. function=transferase activity, transferring nitrogenous groups; Cellular component=chloroplast; Biological process=biosynthetic process
  Homolog annotation: Hit_ID=Q93ZN9; Match level="QueryCoverage=93%, HitCoverage=25%, E-value=4e-55, Identity=80%"; Hit description=LL -diaminopimelate aminotransferase, chloroplastic
GFTGVRLGWTVVPKELXFSDGHPVAKDFNRIVCTCFNGASNIAQAGGLACLSPEGLKAMHDVVGFYKENTEIIVDTFTSLGFNVYGAKNAPYVWVHFPGRNSWDVFAEILEKANIVTTPGSGFGTR

SEQ ID NO: 131802 - protein, 43 aa, Setaria italica
  Transcript Sequence Number=SeqID_65828
  Gene Ontology: Mol. function=transferase activity, transferring groups other than amino-acyl groups
  Homolog annotation: Hit_ID=B6TZ41; Match level="QueryCoverage=100%, HitCoverage=9%, E-value=5e-12, Identity=72%"; Hit description =Transferase
QVTSFKCGGMALGFTWAHLIGDIPLAAACFSTWAQLFSGKNPP

SEQ ID NO: 131803 - protein, 85 aa, Setaria italica
  misc_feature (68)..(68): Xaa can be any naturally occurring amino acid
  Transcript Sequence Number=SeqID_65829
  Gene Ontology: Mol. function=transferase activity
  Homolog annotation: Hit_ID=B3GPG7; Match level="QueryCoverage=60%, HitCoverage=13%, E-value=5e-17, Identity=79%"; Hit description =Spermidine synthase 3
HKCSRLCISRVLIVSLFQTSFSYGTFEFCSGVIGFLLCAKEGPPVNFLTPINPIEKLEGATEAGREIXFYNSEVSFVLSVTQNFL

SEQ ID NO: 131804 - protein, 124 aa, Setaria italica
  Transcript Sequence Number=SeqID_65830
  Gene Ontology: Mol. function=serine-type endopeptidase activity; Cellular component=cytoplasm; Biological process=proteolysis
  Homolog annotation: Hit_ID=B6U134; Match level="QueryCoverage=100%, HitCoverage=14%, E-value=8e-46, Identity=74%"; Hit description =Prolyl endopeptidase
  Pfam annotation: Domain name=Peptidase_S9; Domain location=5-123; Score=-73.6; E_value=0.036; Accession=PF00326.13; Description=Prolyl oligopeptidase family
TRRPPLLPPSIHSRLVAASINQRPDLFGCALAHVGVMDMLRFHKFTIGHAWTTDYGCSDKEEEFQWLIKYSPLHNVRRALFPRSPHIMKGRIFNEPLEQSSGDHCEYPATMLLTADHDDRVVPL

SEQ ID NO: 131805 - protein, 57 aa, Setaria italica
  Transcript Sequence Number=SeqID_65831
  Gene Ontology: Mol. function=serine-type endopeptidase activity; Biological process=proteolysis
  Homolog annotation: Hit_ID=B6U134; Match level="QueryCoverage=68%, HitCoverage=5%, E-value=2e-13, Identity=79%"; Hit description=Prolyl endopeptidase
FLLTISTLIKLNKKLFGPLGTYDGCDPVNKLYYCKISSLPRGIEGFRESQEMLPFVK

SEQ ID NO: 131806 - protein, 40 aa, Setaria italica
  Transcript Sequence Number=SeqID_65832
TTIVCSPDKEEEFQWLIKYSPLHNVRRPWEQSSPHIMKGR

SEQ ID NO: 131807 - protein, 88 aa, Setaria italica
  Transcript Sequence Number=SeqID_65833
  Gene Ontology: Mol. function=serine-type endopeptidase activity; Cellular component=cytoplasm; Biological process=proteolysis
  Homolog annotation: Hit_ID=B6U134; Match level="QueryCoverage=59%, HitCoverage=7%, E-value=1e-24, Identity=94%"; Hit description=Prolyl endopeptidase
MSDRLISFGVALHQAHLKIGPKIYHRGGTKRAQNNDCTSNIRGGGEYGEEWHKAGALAMKQNCFDDFAACAEFLISSGYTSSRRLCIE

SEQ ID NO: 131808 - protein, 36 aa, Setaria italica
  Transcript Sequence Number=SeqID_65834
  Gene Ontology: Mol. function=thioredoxin-disulfide reductase activity; Cellular component=cytoplasm; Biological process=cell redox homeostasis
  Homolog annotation: Hit_ID=B9H9S9; Match level="QueryCoverage=94%, HitCoverage=7%, E-value=7e-14, Identity=97%"; Hit description =Thioredoxin reductase
LRKIYHESPRLICVLYTSPTCGPCRTLKPILSKVSS

SEQ ID NO: 131809 - protein, 77 aa, Setaria italica
  Transcript Sequence Number=SeqID_65835
  Gene Ontology: Mol. function=ATPase activity, coupled to transmembrane movement of substances; Cellular component=integral to membrane; Biological process=transport
  Homolog annotation: Hit_ID=B9MWQ7; Match level="QueryCoverage=100%, HitCoverage=6%, E-value=4e-32, Identity=80%"; Hit description =Multidrug resistance protein ABC transporter family (Fragment)
LIDDLDICTIGLKDLRMKLSIIPQEPTLFRGSVRSNVDPLGLHTDEDIWEALDKCQLKKTISALPGLLESPVSDDGE

SEQ ID NO: 131810 - protein, 44 aa, Setaria italica
  Transcript Sequence Number=SeqID_65836
  Gene Ontology: Mol. function=1-phosphatidylinositol-4-phosphate 5 -kinase activity; Biological process=phosphatidylinositol metabolic process
  Homolog annotation: Hit_ID=Q6EX42; Match level="QueryCoverage=93%, HitCoverage=5%, E-value=1e-12, Identity=82%"; Hit description =Phosphatidylinositol-4-phosphate 5-kinase 1
SAFRFRVQLGVNMPARALKVREDMNTELENPDNIEEYDVVLYLG

SEQ ID NO: 131811 - protein, 41 aa, Setaria italica
  Transcript Sequence Number=SeqID_65837
YLPENGQQKHLTVTTYKLSSNLTIINHLFINIQHLLSMNAW

SEQ ID NO: 131812 - protein, 72 aa, Setaria italica
  misc_feature (1)..(1): Xaa can be any naturally occurring amino acid
  misc_feature (53)..(53): Xaa can be any naturally occurring amino acid
  Transcript Sequence Number=SeqID_65838
  Gene Ontology: Mol. function=1-phosphatidylinositol-4-phosphate 5 -kinase activity; Cellular component=plasma membrane; Biological process=phosphatidylinositol metabolic process
  Homolog annotation: Hit_ID=Q6EX42; Match level="QueryCoverage=90%, HitCoverage=8%, E-value=2e-23, Identity=80%"; Hit description =Phosphatidylinositol-4-phosphate 5-kinase 1
XFHIDAADYMMSLCGDDSLKELSSPGKSGSIFYLSQDERFVIKTLRKAELKVXLQEYLLAYVLFVLNVWMSC

SEQ ID NO: 131813 - protein, 99 aa, Setaria italica
  Transcript Sequence Number=SeqID_65839
  Gene Ontology: Mol. function=1-phosphatidylinositol-4-phosphate 5 -kinase activity; Biological process=phosphatidylinositol metabolic process
  Homolog annotation: Hit_ID=Q6EX42; Match level="QueryCoverage=53%, HitCoverage=6%, E-value=8e-14, Identity=72%"; Hit description =Phosphatidylinositol-4-phosphate 5-kinase 1
EQTLKVEFLDTDLLQYEEKSYVEGFLLVAHEPGTTVGGSHIRGSMVRASEAGYEEVDLVLPGTGRYLFLLRKSLANHLMIQLETEMFQWIAITRMLYEC

SEQ ID NO: 131814 - protein, 87 aa, Setaria italica
  Transcript Sequence Number=SeqID_65840
  Gene Ontology: Mol. function=1-phosphatidylinositol-4-phosphate 5 -kinase activity; Cellular component=plasma membrane; Biological process=phosphatidylinositol metabolic process
  Homolog annotation: Hit_ID=Q6EX42; Match level="QueryCoverage=94%, HitCoverage=10%, E-value=2e-35, Identity=87%"; Hit description =Phosphatidylinositol-4-phosphate 5-kinase 1
VGGSHIRGSMVRASEAGYEEVDLVLPGTGRFRVQLGVNMPARALKVREDMNTELENPDNIEEYDVVLYLGIIDILQEYNVSKSAGRT

SEQ ID NO: 131815 - protein, 87 aa, Setaria italica
  misc_feature (68)..(68): Xaa can be any naturally occurring amino acid
  Transcript Sequence Number=SeqID_65841
  Gene Ontology: Mol. function=protein binding; Cellular component =proteasome regulatory particle; Biological process=anaphase -promoting complex-dependent proteasomal ubiquitin-dependent protein catabolic process
  Homolog annotation: Hit_ID=O24412; Match level="QueryCoverage=87%, HitCoverage=24%, E-value=2e-29, Identity=85%"; Hit description =Probable 26S proteasome non-ATPase regulatory subunit 7
VFPTCNSIVVFLLFTLQDVFNLLPNLNVNELIKAFAVKTNDMMLVIYLSSLIRSVIALHNLINNKMLXNKEHEKAEDSKPTAIPTAA

SEQ ID NO: 131816 - protein, 52 aa, Setaria italica
  Transcript Sequence Number=SeqID_65842
  Subcellular localization annotation: CTP_CleavageSite=32; ConfidenceScore=5.05e-01
IIQCNWFQLPLTLSYMKQTSKCPLKVKTIGSSATMLTCHTFHPFPRPFSMVA

SEQ ID NO: 131817 - protein, 51 aa, Setaria italica
  Transcript Sequence Number=SeqID_65843
  Homolog annotation: Hit_ID=O24412; Match level="QueryCoverage=96%, HitCoverage=15%, E-value=1e-17, Identity=89%"; Hit description =Probable 26S proteasome non-ATPase regulatory subunit 7
KTNDMMLVIYLSSLIRSVIALHNLINNKMLNKEHEKAEDSKPTAIPTAAGS

SEQ ID NO: 131818 - protein, 58 aa, Setaria italica
  Transcript Sequence Number=SeqID_65844
  Gene Ontology: Mol. function=zinc ion binding; Cellular component =intracellular
  Homolog annotation: Hit_ID=B6TCQ2; Match level="QueryCoverage=96%, HitCoverage=13%, E-value=2e-23, Identity=91%"; Hit description=CCT motif family protein
  Pfam annotation: Domain name=PHD; Domain location=4-54; Score=-5.2; E_ value=0.097; Accession=PF00628.21; Description=PHD-finger
  Pfam annotation: Domain name=zf-B_box; Domain location=1-47; Score =46.5; E_value=1.1e-10; Accession=PF00643.16; Description=B-box zinc finger
  Pfam module annotation: Pfam domain module=PHD::zf-B_box; Domain location=4-54::1-47
MAALCDFCGKQRSMIYCRSDAASLCLSCDRSVHSANALSRRHTRTLLCDRCGSQPAAA

SEQ ID NO: 131819 - protein, 85 aa, Setaria italica
  Transcript Sequence Number=SeqID_65845
RYVEQFLVCWLVCVAYRNVDEFSDVMLYMQMPIWNVDCAIVPCLGLVRGTVGVVVSSKSWYGPIGLVSGSRQSQSQSAGSVLGLQ

SEQ ID NO: 131820 - protein, 114 aa, Setaria italica
  misc_feature (72)..(72): Xaa can be any naturally occurring amino acid
  Transcript Sequence Number=SeqID_65846
  Gene Ontology: Mol. function=protein transporter activity; Cellular component=nuclear pore; Biological process=intracellular protein transport
  Homolog annotation: Hit_ID=Q9SLX0; Match level="QueryCoverage=93%, HitCoverage=20%, E-value=3e-49, Identity=87%"; Hit description =Importin subunit alpha-1b
  Pfam annotation: Domain name=Arm; Domain location=1-33; Score=4.4; E _value=3.4; Accession=PF00514.15; Description=Armadillobeta-catenin -like repeat
  Pfam annotation: Domain name=Arm; Domain location=35-75; Score=52.3; E_value=1.9e-12; Accession=PF00514.15; Description=Armadillobeta -catenin-like repeat
  Pfam annotation: Domain name=Arm; Domain location=77-114; Score=17.5; E_value=0.056; Accession=PF00514.15; Description=Armadillobeta -catenin-like repeat
  Pfam annotation: Domain name=HEAT; Domain location=4-35; Score=0.7; E_ value=40; Accession=PF02985.14; Description=HEAT repeat
  Pfam annotation: Domain name=HEAT; Domain location=41-77; Score=25.6; E_value=0.00021; Accession=PF02985.14; Description=HEAT repeat
  Pfam module annotation: Pfam domain module=Arm::Arm::Arm::HEAT::HEAT; Domain location=1-33::35-75::77-114::4-35::41-77
LVVLRILFVVSFTREDHPQLQFEAAWALTNIASGTSENTKVVVESGAVPIFVKLLNSHSEDVREQAVWALGXVAGDSPKCRDLVLGHGGLFPLLQQLNEHAKLSMLRNATWTLS

SEQ ID NO: 131821 - protein, 58 aa, Setaria italica
  Transcript Sequence Number=SeqID_65847
IRKAKREESLQKRRHVGFAASATGAVPPMGHSSALQQKVRPPIPLDLPRSDPPARSLG

SEQ ID NO: 131822 - protein, 38 aa, Setaria italica
  Transcript Sequence Number=SeqID_65848
PTTYEQRTLLIFQNLVYHLFLLSWLKVHCFSYGSKKGQ

SEQ ID NO: 131823 - protein, 81 aa, Setaria italica
  misc_feature (39)..(39): Xaa can be any naturally occurring amino acid
  Transcript Sequence Number=SeqID_65849
  Gene Ontology: Mol. function=catalytic activity; Cellular component =plasma membrane; Biological process=metabolic process
  Homolog annotation: Hit_ID=B6SW95; Match level="QueryCoverage=79%, HitCoverage=11%, E-value=3e-30, Identity=92%"; Hit description =Neutral/alkaline invertase
FASLATPDQASAIMDLIEERWEELVGEMPVKICFPAIEXHEWQIVTGCDPKNTRWSYHNGGSWPGQPLSSLIRCSRSEGCF

SEQ ID NO: 131824 - protein, 80 aa, Setaria italica
  Transcript Sequence Number=SeqID_65850
  Gene Ontology: Mol. function=ATP binding; Biological process=apoptosis
  Homolog annotation: Hit_ID=Q2R1P5; Match level="QueryCoverage=95%, HitCoverage=5%, E-value=4e-22, Identity=76%"; Hit description =Leucine Rich Repeat family protein, expressed
DCTEGKLTFKKDRFISLKCLFVEGSDLTNITFEDEAACELEKMVLSFTSTESISGVDRLPKLEELELNNSSGRLLSSFEN

SEQ ID NO: 131825 - protein, 127 aa, Setaria italica
  misc_feature (15)..(15): Xaa can be any naturally occurring amino acid
  Transcript Sequence Number=SeqID_65851
  Gene Ontology: Mol. function=inositol or phosphatidylinositol phosphatase activity; Biological process=abscisic acid mediated signaling
  Homolog annotation: Hit_ID=B9SNR8; Match level="QueryCoverage=95%, HitCoverage=16%, E-value=8e-47, Identity=66%"; Hit description=Type I inositol polyphosphate 5-phosphatase, putative
CFVCSHLASGHKSGXKQKRNADVYEILQRTRFSSLCAAGRPQKIPSHDRIFWFGDLNYRIDLLDAEVRHLVAMKRWDDLLKSDQLTKELISGSTFVGWKEGLINFPPTYKYERNSSRYVGEIHNEVG

SEQ ID NO: 131826 - protein, 59 aa, Setaria italica
  misc_feature (48)..(48): Xaa can be any naturally occurring amino acid
  Transcript Sequence Number=SeqID_65852
  Gene Ontology: Mol. function=inositol or phosphatidylinositol phosphatase activity
  Homolog annotation: Hit_ID=Q5Z483; Match level="QueryCoverage=83%, HitCoverage=10%, E-value=2e-14, Identity=77%"; Hit description =Putative inositol polyphosphate 5-phosphatase II
SDFRISFWSSRIFWFGDLNYRIDLLDAEVRHLVAMKRWDDLLKSDQLXTKELISGSTFV

SEQ ID NO: 131827 - protein, 151 aa, Setaria italica
  misc_feature (97)..(97): Xaa can be any naturally occurring amino acid
  Transcript Sequence Number=SeqID_65853
  Gene Ontology: Mol. function=nucleotide binding; Biological process =defense response
  Homolog annotation: Hit_ID=Q6WSR3; Match level="QueryCoverage=97%, HitCoverage=12%, E-value=4e-50, Identity=65%"; Hit description =Resistance protein T10rga2-1A
  Pfam annotation: Domain name=LRR_1; Domain location=112-134; Score =13.2; E_value=0.89; Accession=PF00560.25; Description=Leucine Rich Repeat
  Pfam annotation: Domain name=LRR_1; Domain location=136-150; Score =5.4; E_value=28; Accession=PF00560.25; Description=Leucine Rich Repeat
  Pfam annotation: Domain name=LRR_1; Domain location=87-110; Score =5.1; E_value=32; Accession=PF00560.25; Description=Leucine Rich Repeat
  Pfam module annotation: Pfam domain module=LRR_1::LRR_1::LRR_1; Domain location=112-134::136-150::87-110
GKNYSFQLHDIMRQICISKAREENLVLTLEEGCSLCSTNGTIRHLAISSNWERDKDAFETMLDLSHLRSLTVFGNWGSFFISSKMRFLRVLDLEDTXGISDHDLDQICKLFHLKYLSLRGCENIHHLPDSIGNLRNLQTLDVSGTRISELP

SEQ ID NO: 131828 - protein, 106 aa, Setaria italica
  misc_feature (85)..(85): Xaa can be any naturally occurring amino acid
  Transcript Sequence Number=SeqID_65854
  Gene Ontology: Mol. function=nucleotide binding; Biological process =defense response
  Homolog annotation: Hit_ID=C1KD92; Match level="QueryCoverage=96%, HitCoverage=30%, E-value=4e-31, Identity=64%"; Hit description=RGA2 (Fragment)
IIVYYSKAREENLVLTLEEGCSLCSTNGTIRHLAISSNWERDKDAFETMLDLSHLRSLTVFGNWGSFFISSKMRFLRVLDLEDTXGISDHDLDQICKLFHLKYLFS

SEQ ID NO: 131829 - protein, 43 aa, Setaria italica
  Transcript Sequence Number=SeqID_65855
LVLGDTTIKGKLKWNANARIYGRDLNYLRHSCCSNTHGPIMAC

SEQ ID NO: 131830 - protein, 43 aa, Setaria italica
  Transcript Sequence Number=SeqID_65856
LIQTGSQIAETRTLHVGKISTGSWIWYCSIRIVRFLFCSYLLI

SEQ ID NO: 131831 - protein, 64 aa, Setaria italica
  misc_feature (32)..(32): Xaa can be any naturally occurring amino acid
  Transcript Sequence Number=SeqID_65857
GLAKYMEWSANMLGAETKRKLKNAELQAKKEXLRIWTPATEASLDTSPSNPILPSLQPWRPPRR

SEQ ID NO: 131832 - protein, 58 aa, Setaria italica
  Transcript Sequence Number=SeqID_65858
DNVALMQFLVLLKSSSHNRHRNPYTFSISKLKYDNKVFMLKSILYFRVALVVGQGETR

SEQ ID NO: 131833 - protein, 83 aa, Setaria italica
  Transcript Sequence Number=SeqID_65859
LNASQDFRGFFFQYCAACLHINVNVCTIQEFRRNSINKDDKLFFPQIIPTHKLVMEPSHQQLLVMESLKLFTFWAPEVHLVSP

SEQ ID NO: 131834 - protein, 119 aa, Setaria italica
  misc_feature (110)..(110): Xaa can be any naturally occurring amino acid
  misc_feature (117)..(117): Xaa can be any naturally occurring amino acid
  Transcript Sequence Number=SeqID_65860
  Gene Ontology: Cellular component=nucleus; Biological process =interspecies interaction between organisms
  Homolog annotation: Hit_ID=Q8H0J6; Match level="QueryCoverage=97%, HitCoverage=13%, E-value=7e-57, Identity=92%"; Hit description =Retinoblastoma-related protein 2
YYLYPNLPDMSPKKVSSSHNVYVSPLRQTKMDLLLSPSSRSFYACIGEGTHAYQSPSKDLAAINSRLNYNGRRINTRINFDMVSDSVVAGSLGQPNGGSTSLDPAAAFSXPSKKRKXDT

SEQ ID NO: 131835 - protein, 96 aa, Setaria italica
  Transcript Sequence Number=SeqID_65861
  Gene Ontology: Cellular component=nucleus; Biological process =interspecies interaction between organisms
  Homolog annotation: Hit_ID=Q8H0J6; Match level="QueryCoverage=91%, HitCoverage=10%, E-value=2e-40, Identity=92%"; Hit description =Retinoblastoma-related protein 2
HILLCATCQMDLLLSPSSRSFYACIGEGTHAYQSPSKDLAAINSRLNYNGRRINTRINFDMVSDSVVAGSLGQPNGGSTSLDPAAAFSSPSKKRKP

SEQ ID NO: 131836 - protein, 122 aa, Setaria italica
  Transcript Sequence Number=SeqID_65862
  Gene Ontology: Cellular component=nucleus; Biological process =interspecies interaction between organisms
  Homolog annotation: Hit_ID=Q8H0J6-2; Match level="QueryCoverage=91%, HitCoverage=13%, E-value=9e-53, Identity=88%"; Hit description =Isoform 2 of Retinoblastoma-related protein 2
  Pfam annotation: Domain name=RB_B; Domain location=1-51; Score=-35.0; E_value=0.00016; Accession=PF01857.12; Description=Retinoblastoma -associated protein B domain
ILNNYKREPQCKPEVFLSIYVGSRNRNGVLGSRHVDIITFYNEVFVPAAKPFLVSFIGSGTRPEDKKNANSQIFGSPKPSPFPNLPDMSPKKVSSSHNVYVSPLRQTKMDLLTLQPKLPRKF

SEQ ID NO: 131837 - protein, 66 aa, Setaria italica
  Transcript Sequence Number=SeqID_65863
  Subcellular localization annotation: CTP_CleavageSite=44; ConfidenceScore=5.07e-01
CRGNKKEGNGGYVVRRVPTLIWWAVSSERSGLSPFSSAASMVLVGGSRSGALSWPSSNGRCRPRRR

SEQ ID NO: 131838 - protein, 75 aa, Setaria italica
  misc_feature (8)..(8): Xaa can be any naturally occurring amino acid
  Transcript Sequence Number=SeqID_65864
PNGRLLLXFPFCPPCPGVTFTTKFLTITNNTTLILISLIIIANTPRRPRPQPHTQAARAKLGDGTGTPPPPAPAT

SEQ ID NO: 131839 - protein, 122 aa, Setaria italica
  misc_feature (56)..(56): Xaa can be any naturally occurring amino acid
  Transcript Sequence Number=SeqID_65865
  Gene Ontology: Mol. function=protein dimerization activity; Cellular component=nucleus; Biological process=regulation of transcription, DNA-dependent
  Homolog annotation: Hit_ID=Q7F7E4; Match level="QueryCoverage=100%, HitCoverage=45%, E-value=3e-44, Identity=77%"; Hit description =Putative transcription factor HBP-1b-wheat
MWKTPAERCFPWLGGFRPSELLKLLANHLEPLTEQQLLGLTNLQQSYPRQGQEGIXLSQGMEALQQSLAETLAGSLGPSGSSGNVANYMGQMAMAMGKLGTLENFLRQADNLRQQTLHQMQR

SEQ ID NO: 131840 - protein, 47 aa, Setaria italica
  Transcript Sequence Number=SeqID_65866
  Pfam annotation: Domain name=bZIP_1; Domain location=2-44; Score=5.3; E_value=0.092; Accession=PF00170.13; Description=bZIP transcription factor
  Pfam annotation: Domain name=bZIP_2; Domain location=1-46; Score=7.3; E_value=0.087; Accession=PF07716.7; Description=Basic region leucine zipper
  Pfam module annotation: Pfam domain module=bZIP_1::bZIP_2; Domain location=2-44::1-46
TLRRLAQNREAARKSRLRKKAYVQQLESSKLKLAQLEQELQKARQQG

SEQ ID NO: 131841 - protein, 67 aa, Setaria italica
  Transcript Sequence Number=SeqID_65867
  Gene Ontology: Mol. function=protein dimerization activity; Cellular component=nucleus; Biological process=regulation of transcription, DNA-dependent
  Homolog annotation: Hit_ID=B9RG75; Match level="QueryCoverage=77%, HitCoverage=11%, E-value=3e-19, Identity=78%"; Hit description =Transcription factor HBP-1b(C1), putative
MVPLCCYFDSAKYYLQGIFISSSGDQTHAMSGNGALTFDIEYTRWLEEQNKQINELRTAVNAHASDS

SEQ ID NO: 131842 - protein, 80 aa, Setaria italica
  Transcript Sequence Number=SeqID_65868
  Gene Ontology: Mol. function=zinc ion binding; Cellular component =intracellular
GNGSDSLPDWPVDEFFNNSEYSPNFSFVEHGSSESDNAKLGSAGGSPQCRLAEGFVAEELLRTKVDLGIRYKRIEIIIEE

SEQ ID NO: 131843 - protein, 90 aa, Setaria italica
  Transcript Sequence Number=SeqID_65869
PGRDLPTAPSVYAAGGDWGGVSWMEPPASYMAPVAAPAATPPGYKGEASQSSPYGMYARNHFSNFAGVRSLRSESSNSVSEKQPGTCPES

SEQ ID NO: 131844 - protein, 66 aa, Setaria italica
  Transcript Sequence Number=SeqID_65870
  Gene Ontology: Mol. function=nucleic acid binding; Cellular component= intracellular; Biological process=ATP synthesis coupled proton transport
  Homolog annotation: Hit_ID=Q10DW2; Match level="QueryCoverage=100%, HitCoverage=17%, E-value=2e-29, Identity=93%"; Hit description =Splicing factor 3A subunit 3, putative, expressed
RCLGIPNTKNFNEITSIEEARGLWEKIQARQGLNKWRPDLEEEYEDQEGNIYNKKTYTDLQRQGLI

SEQ ID NO: 131845 - protein, 90 aa, Setaria italica
  Transcript Sequence Number=SeqID_65871
GLGVRGKVVVVATRAATRKRKKREKRKWKRKKQERQKEVEDRMLEKITKKFQAEKAEKQSKQIKLCSKVPPSSKRSFFGGGGPSSLSNSN

SEQ ID NO: 131846 - protein, 129 aa, Setaria italica
  Transcript Sequence Number=SeqID_65872
  Gene Ontology: Mol. function=hydrolase activity, acting on ester bonds; Biological process=lipid metabolic process
  Homolog annotation: Hit_ID=Q2QU40; Match level="QueryCoverage=58%, HitCoverage=18%, E-value=1e-16, Identity=57%"; Hit description=GDSL -motif lipase/hydrolase, putative
SILSFVGVLGSNDYLNNYFMPNYYDTARRYSPRDYAALLLQGYAAQITELYGLGARKFVVAGVGQIGCIPYELARMNNDNQPDTPSSVGSEDIATATAAARRRRATGRGEGDATPGASATSRPIPAPAL

SEQ ID NO: 131847 - protein, 23 aa, Setaria italica
  Transcript Sequence Number=SeqID_65873
DFAEVCFKEFGDRVKDWTTFNEP

SEQ ID NO: 131848 - protein, 68 aa, Setaria italica
  misc_feature (1)..(23): Xaa can be any naturally occurring amino acid
  Transcript Sequence Number=SeqID_65874
XXXXXXXXXXXXXXXXXXXXXXXLELLLFPFPASTLHDSNSDPIDYRHTQQQSLKQTHPVPIPSKYRR

SEQ ID NO: 131849 - protein, 46 aa, Setaria italica
  misc_feature (20)..(20): Xaa can be any naturally occurring amino acid
  Transcript Sequence Number=SeqID_65875
  Gene Ontology: Mol. function=hydrolase activity, hydrolyzing O -glycosyl compounds; Biological process=carbohydrate metabolic process
WTFMDCFEWGDGYLDRFGLXFIDRLNGLKRYRKQSSYWIENFLKRY

SEQ ID NO: 131850 - protein, 57 aa, Setaria italica
  Transcript Sequence Number=SeqID_65876
LIIKPIQSLITNKSTKEDRTKRKIRRGYVSSPQANKQYLQVLVRIKHRWSAVHCIYA

SEQ ID NO: 131851 - protein, 70 aa, Setaria italica
  misc_feature (31)..(31): Xaa can be any naturally occurring amino acid
  Transcript Sequence Number=SeqID_65877
  Gene Ontology: Mol. function=ATP-dependent helicase activity
MKAYIPTSTCRTNRVKTTAQANDCTVTTKWXFYRISKSSNKISDSVELNLPPYSFVSQVCGSCMIILVIL

SEQ ID NO: 131852 - protein, 42 aa, Setaria italica
  Transcript Sequence Number=SeqID_65878
  Gene Ontology: Mol. function=phosphatidate cytidylyltransferase activity; Cellular component=membrane; Biological process =phospholipid biosynthetic process
  Homolog annotation: Hit_ID=B6TI87; Match level="QueryCoverage=92%, HitCoverage=10%, E-value=7e-14, Identity=100%"; Hit description =Phosphatidate cytidylyltransferase
ATAYGILIFLGSLFGDLVESLIKRDAGVKDSGSLIPGHGKLC

SEQ ID NO: 131853 - protein, 48 aa, Setaria italica
  Transcript Sequence Number=SeqID_65879
  Homolog annotation: Hit_ID=Q9XIC8; Match level="QueryCoverage=79%, HitCoverage=6%, E-value=6e-12, Identity=76%"; Hit description =F23M19.10
SVFFVVSICFRECPIDLKEAISSICFAAPRCADLPELMQVQMMFATKY

SEQ ID NO: 131854 - protein, 133 aa, Setaria italica
  misc_feature (115)..(115): Xaa can be any naturally occurring amino acid
  Transcript Sequence Number=SeqID_65880
QITLEYRHLSFLGKAYEAFLVLHEMIEKDITPNDITDSLVVDCLCREGKFLVALSYLNRSLEDGLSRSAVSSIVRGLIAGGKLHELHTLIRWILGQGFILDVYMYQELIIAFCKXGYCRGTEMYKVSHTLERC

SEQ ID NO: 131855 - protein, 74 aa, Setaria italica
  Transcript Sequence Number=SeqID_65881
AADDLLGKSLNAIKGAQDKIRHAASERRQSLQLQLLEDIANQLQQISGLDYKPKTIFTQPIVFSRHNIPLLAFL

SEQ ID NO: 131856 - protein, 79 aa, Setaria italica
  Transcript Sequence Number=SeqID_65882
PGLYSSQHTYITGLQTAKWIPCLFIYMYKIIIHIYLKQQAKLDESTNQWTRLQTKNNIYTANRVFATQYSSPHKLISFK

SEQ ID NO: 131857 - protein, 81 aa, Setaria italica
  Transcript Sequence Number=SeqID_65883
  Gene Ontology: Mol. function=hydrolase activity, acting on ester bonds; Biological process=lipid metabolic process
  Homolog annotation: Hit_ID=B9SYX7; Match level="QueryCoverage=82%, HitCoverage=11%, E-value=2e-18, Identity=52%"; Hit description=Zinc finger protein, putative
FPLSLLSLRRYISVYESFLNLITDPAKFGLENVEEGCCATGKFEMGFMCNDDAPLTCDDADKFLFWDAFHPTEKVNRLMAN

SEQ ID NO: 131858 - protein, 78 aa, Setaria italica
  Transcript Sequence Number=SeqID_65884
  Gene Ontology: Mol. function=hydrolase activity, acting on ester bonds; Biological process=lipid metabolic process
  Homolog annotation: Hit_ID=B9SSJ0; Match level="QueryCoverage=97%, HitCoverage=21%, E-value=3e-16, Identity=43%"; Hit description=Zinc finger protein, putative
VLLVRGLRAEFPKLKLAYISVYESFLNLITDPAKFGLENVEEGCCATGKFEMGFMCNDDAPLTCDDADKFLFWDAFHP

SEQ ID NO: 131859 - protein, 64 aa, Setaria italica
  Transcript Sequence Number=SeqID_65885
  Gene Ontology: Mol. function=phosphoinositide binding; Biological process=cell communication
  Homolog annotation: Hit_ID=B4FAI4; Match level="QueryCoverage=70%, HitCoverage=8%, E-value=6e-14, Identity=84%"; Hit description=PX domain containing protein
THALKELELIKENNMNEIKRFNKERRHDLVEMLKGFVSDQVEVLDFITWFIFGWLFAVDTKLLI

SEQ ID NO: 131860 - protein, 38 aa, Setaria italica
  Transcript Sequence Number=SeqID_65886
  Subcellular localization annotation: CTP_CleavageSite=5; ConfidenceScore=5.18e-01
PPPPSSATTPSYHSPPQGSPTTPSYPSPPSSATTPPTT

SEQ ID NO: 131861 - protein, 144 aa, Setaria italica
  Transcript Sequence Number=SeqID_65887
  Gene Ontology: Mol. function=metal ion binding
  Homolog annotation: Hit_ID=B4FM57; Match level="QueryCoverage=70%, HitCoverage=41%, E-value=1e-38, Identity=77%"; Hit description=PHD finger protein
KLRQEERKKPSRPSNGLPNGSWEVSLPAEEVPPEMPEPALGINFARDGMKRRDWLSLVAVHSDAWLVSVAYFFAARLNGNDRKRLFNMINDHPSVYEAMVDRKQRENKSGVDNSGKSRHSTKVTTSHHTSLFSLCQNIMQLSAF

SEQ ID NO: 131862 - protein, 68 aa, Setaria italica
  Transcript Sequence Number=SeqID_65888
MHNRLATYCLFCLFSSTLCNSLYVMQVSRMEVLEHVSSILKDYGFLPTEEVMDTINLQPYDCKMSEQK

SEQ ID NO: 131863 - protein, 65 aa, Setaria italica
  Transcript Sequence Number=SeqID_65889
  Gene Ontology: Mol. function=hydrolase activity; Biological process =metabolic process
  Homolog annotation: Hit_ID=B6TKL4; Match level="QueryCoverage=100%, HitCoverage=15%, E-value=4e-35, Identity=96%"; Hit description=CHY1
QTVGECLRREYRMVCHVMRGDFSRDFFEGCRAILVDKDRNPKWMPPRLEQVHDEAVEQYFSRIDD

SEQ ID NO: 131864 - protein, 111 aa, Setaria italica
  Transcript Sequence Number=SeqID_65890
  Gene Ontology: Mol. function=phosphoprotein phosphatase activity; Cellular component=plastid stroma
  Homolog annotation: Hit_ID=B9G2K8; Match level="QueryCoverage=81%, HitCoverage=35%, E-value=3e-48, Identity=97%"; Hit description =Serine/threonine protein phosphatase
VLKLSLPFLFVIGVLLLLYLLWSDPEDAVDGWGLSPRGAGFLFGGNVVSSFNHSNNIDYICRAHQLVMEGYKWMFNNKIVTVWSAPNYCYRCGNVAAILELDENLNKQFRV

SEQ ID NO: 131865 - protein, 89 aa, Setaria italica
  Transcript Sequence Number=SeqID_65891
  Gene Ontology: Mol. function=transcription initiation factor activity; Cellular component=transcription factor TFIID complex; Biological process=transcription initiation
  Homolog annotation: Hit_ID=Q10IY9; Match level="QueryCoverage=100%, HitCoverage=12%, E-value=6e-30, Identity=73%"; Hit description =Transcription initiation factor TFIID component TAF4 family protein, expressed
KCNLKVIGTDVERCLSMCVEERLRGFISDIIRFSKQRVDVEKSRHRFYPLSSDVRSHIMRVNREAKEQWEKKQAEDAERIRKQNDVSSA

SEQ ID NO: 131866 - protein, 46 aa, Setaria italica
  Transcript Sequence Number=SeqID_65892
  Gene Ontology: Mol. function=hydrolase activity, acting on carbon -nitrogen (but not peptide) bonds, in linear amides; Biological process=metabolic process
  Homolog annotation: Hit_ID=Q94CA8; Match level="QueryCoverage=69%, HitCoverage=7%, E-value=3e-11, Identity=96%"; Hit description =Putative formamidase
YFNIRDWGFDTCISLLSCCPCEGRISGIVDSPNAVTTLAIPTAIFD

SEQ ID NO: 131867 - protein, 80 aa, Setaria italica
  Transcript Sequence Number=SeqID_65893
  Gene Ontology: Mol. function=hydrolase activity, acting on carbon -nitrogen (but not peptide) bonds, in linear amides; Biological process=metabolic process
  Homolog annotation: Hit_ID=B9SGY7; Match level="QueryCoverage=68%, HitCoverage=12%, E-value=7e-25, Identity=92%"; Hit description =Acetamidase, putative
VRGEAACRAVLNAIEYLSRFGYSKEQVYLLLSCCPCEGRISGIVDSPNAVATLAIPTAIFDQVCLQQTNTNFLCSLKLLD

SEQ ID NO: 131868 - protein, 56 aa, Setaria italica
  Transcript Sequence Number=SeqID_65894
  Gene Ontology: Mol. function=hydrolase activity, acting on carbon -nitrogen (but not peptide) bonds, in linear amides; Cellular component=cytoplasm; Biological process=metabolic process
  Homolog annotation: Hit_ID=Q9SZE9; Match level="QueryCoverage=98%, HitCoverage=12%, E-value=2e-21, Identity=85%"; Hit description =Formamidase-like protein
MQIQEGTAEWHKIANGAARTIPGRENGGNCDIKNLSRGSKVYLPIFVEGANLSTGD

SEQ ID NO: 131869 - protein, 45 aa, Setaria italica
  Transcript Sequence Number=SeqID_65895
EPPSISTNSVASRFVSFNLQRVESHLYDFFLTYGTSNAVLYADIV

SEQ ID NO: 131870 - protein, 106 aa, Setaria italica
  misc_feature (78)..(78): Xaa can be any naturally occurring amino acid
  Transcript Sequence Number=SeqID_65896
  Homolog annotation: Hit_ID=Q7XLY4; Match level="QueryCoverage=87%, HitCoverage=40%, E-value=7e-15, Identity=51%"; Hit description =OSJNBa0042I15.6 protein
WRVADLVAAAVGLYVRDGRRPLLPSGDPSAFGLHYSQFSLQGLDPDEKVVELGSRSFFLYPRAAAAAAASSFSYPSTXSQQAMATPAERPNMLPPCLGFMHFWPLL

SEQ ID NO: 131871 - protein, 92 aa, Setaria italica
  misc_feature (64)..(64): Xaa can be any naturally occurring amino acid
  Transcript Sequence Number=SeqID_65897
  Subcellular localization annotation: CTP_CleavageSite=51; ConfidenceScore=5.21e-01
LRRQPRPWGRGRSSCSPAPRLSRPGPKPCRTELGVVELGSRSFFLYPRAAAAAAASSFSYPSTXSQQDHGHPAERPNMLPPCLGFMHFWPLL

SEQ ID NO: 131872 - protein, 129 aa, Setaria italica
  misc_feature (68)..(68): Xaa can be any naturally occurring amino acid
  misc_feature (106)..(106): Xaa can be any naturally occurring amino acid
  Transcript Sequence Number=SeqID_65898
  Gene Ontology: Cellular component=plasma membrane
  Homolog annotation: Hit_ID=Q7XTT0; Match level="QueryCoverage=95%, HitCoverage=22%, E-value=4e-11, Identity=32%"; Hit description =OSJNBa0035M09.19 protein
EDNRLPPWLAAQYAQYLEVVSGHWNQRGKPAMQNFLQKASEKSAQAKKWAEPHIETAKTKWIPFAKEXLVVLKKNAEPYVQKISTRSVELYESSRVAVTPHVVKVXELADPYYQEAKKFSKPYIDQVAE

SEQ ID NO: 131873 - protein, 120 aa, Setaria italica
  misc_feature (45)..(45): Xaa can be any naturally occurring amino acid
  misc_feature (77)..(77): Xaa can be any naturally occurring amino acid
  misc_feature (108)..(108): Xaa can be any naturally occurring amino acid
  Transcript Sequence Number=SeqID_65899
  Gene Ontology: Cellular component=plasma membrane
RTKQLTEVHGAWLPPWLAAQYAQYLEVVSGHWNQRGKPAMQNFFXKASEKSAQAKKWAEPHIETAKTKWIPFAKEKXLVVLKKNAEPYVQKISTRSVELYESSRVAVXPHVVKVKNLLIL

SEQ ID NO: 131874 - protein, 62 aa, Setaria italica
  Transcript Sequence Number=SeqID_65900
  Subcellular localization annotation: CTP_CleavageSite=37; ConfidenceScore=5.60e-01
PHQLPPSATFKSTFCLLDFALFVHHFSFWITLSFAVSSSTFFSASLALDSSAVLWLTMQRRR

SEQ ID NO: 131875 - protein, 42 aa, Setaria italica
  misc_feature (11)..(11): Xaa can be any naturally occurring amino acid
  Transcript Sequence Number=SeqID_65901
ARFRSVFTWRXNPLVLPTTHHIQILRIYDHMIMCSVIRNICM

SEQ ID NO: 131876 - protein, 46 aa, Setaria italica
  Transcript Sequence Number=SeqID_65902
RWKADEVARWLNYRGRDILTSFRPIVYDNTVPICQTFRLPLLLGAE

SEQ ID NO: 131877 - protein, 48 aa, Setaria italica
  Transcript Sequence Number=SeqID_65903
  Gene Ontology: Cellular component=plasma membrane
  Homolog annotation: Hit_ID=B6T1M4; Match level="QueryCoverage=97%, HitCoverage=17%, E-value=5e-10, Identity=70%"; Hit description=Expp1 protein
  Subcellular localization annotation: CTP_CleavageSite=16; ConfidenceScore=5.13e-01
SFHPVLFQSSSGGYMVAFAGRKYAARSAPVFVGNSSYTVTSFTLVLEF

SEQ ID NO: 131878 - protein, 79 aa, Setaria italica
  Transcript Sequence Number=SeqID_65904
FAELVTDHKYMSQENDHIGSPLVLSKVMYLSNINDSLSVAAVPVGARCDDFSTDPNLREEHWLASLTFFDLSIRPPAYL

SEQ ID NO: 131879 - protein, 75 aa, Setaria italica
  Transcript Sequence Number=SeqID_65905
  Gene Ontology: Mol. function=amino acid transmembrane transporter activity; Cellular component=integral to membrane; Biological process=amino acid transport
  Homolog annotation: Hit_ID=B6U8D2; Match level="QueryCoverage=100%, HitCoverage=15%, E-value=3e-26, Identity=76%"; Hit description=YfnA
RWNDKATSRRSLGIMSIWQEGVLCLVIVALCGFIVGLCYRYNYAIAFMVVAFLIAIAASFALQFRQVYVDPPGFS

SEQ ID NO: 131880 - protein, 38 aa, Setaria italica
  Transcript Sequence Number=SeqID_65906
  Gene Ontology: Mol. function=amino acid transmembrane transporter activity; Cellular component=integral to membrane; Biological process=amino acid transport
  Homolog annotation: Hit_ID=B6U8D2; Match level="QueryCoverage=100%, HitCoverage=8%, E-value=9e-13, Identity=92%"; Hit description=YfnA
MVLFAQLHEEAWYRFVILSLIAVGIYAGYGQYNAAPCS

SEQ ID NO: 131881 - protein, 57 aa, Setaria italica
  Transcript Sequence Number=SeqID_65907
PPYFVGSPPVRATNPLVHDAQFCAWKVQSVDQSLGIPIPTKGYNARYCAGKGSVTKA

SEQ ID NO: 131882 - protein, 135 aa, Setaria italica
  Transcript Sequence Number=SeqID_65908
  Gene Ontology: Mol. function=oxidoreductase activity; Biological process=oxidation reduction
  Homolog annotation: Hit_ID=B3TM13; Match level="QueryCoverage=78%, HitCoverage=33%, E-value=1e-45, Identity=83%"; Hit description=Short- chain dehydrogenase Tic32
KINDESVYSSIGAYGQSKLANILHANELARRFKEEDVNITANSLHPGSIVTNLLRYHSILDVLHRTLGKLVLKNAQQGAATTCYVALHPQVKGVSGKYFCDSNLYEDRRRRKDQRNNRTTRTKEGLLGIYKNKLT

SEQ ID NO: 131883 - protein, 50 aa, Setaria italica
  misc_feature (22)..(22): Xaa can be any naturally occurring amino acid
  Transcript Sequence Number=SeqID_65909
  Gene Ontology: Mol. function=oxidoreductase activity; Biological process=oxidation reduction
MKKTSHESSAKGIEMQFATNHXVGHFLLTHLLLDTMKKTSHESNVDNSSF

SEQ ID NO: 131884 - protein, 44 aa, Setaria italica
  Transcript Sequence Number=SeqID_65910
LPLNILVNNAGKTSHESNVEGRIVNVSSEGHRFTYGEGIRFDKI

SEQ ID NO: 131885 - protein, 84 aa, Setaria italica
  Transcript Sequence Number=SeqID_65911
  Gene Ontology: Mol. function=acyl carrier activity; Cellular component=chloroplast; Biological process=fatty acid biosynthetic process
MLIYIKISPPRSQACTDYKRECGRDSVLQSHTTVHTDCNSESGETTLHCEHLLSLESGPTMVKARTMWRPKGTKAQETVIPSSL

SEQ ID NO: 131886 - protein, 72 aa, Setaria italica
  Transcript Sequence Number=SeqID_65912
  Gene Ontology: Mol. function=microtubule motor activity; Cellular component=microtubule associated complex; Biological process =microtubule-based movement
  Homolog annotation: Hit_ID=Q93XF9; Match level="QueryCoverage=95%, HitCoverage=17%, E-value=7e-28, Identity=91%"; Hit description =Kinesin heavy chain (Fragment)
MLLLTQKFSSAGGHAKTLMFVQINPDVSSYSETLSTLKFAERVSGVELGAAKANKEGKDIREFMEQLSLLKE

SEQ ID NO: 131887 - protein, 62 aa, Setaria italica
  Transcript Sequence Number=SeqID_65913
LLLVFSKINLMRAREEKYKSRIRVLEALASGMSGQTQIHSNATNGKANVAADYVIEDGQKQR

SEQ ID NO: 131888 - protein, 43 aa, Setaria italica
  Transcript Sequence Number=SeqID_65914
  Gene Ontology: Mol. function=binding
  Homolog annotation: Hit_ID=B4FYX3; Match level="QueryCoverage=88%, HitCoverage=12%, E-value=5e-13, Identity=92%"; Hit description =Pollenless3
MNQLVEKQPDLAIVWFWKAINSGDRVDSALKDMAVVMKQHYSH

SEQ ID NO: 131889 - protein, 116 aa, Setaria italica
  misc_feature (69)..(69): Xaa can be any naturally occurring amino acid
  Transcript Sequence Number=SeqID_65915
VVTSSSFGPGGLDSMALSFEDCPDSSEVSMKHELGQDNIESLAMSDDGQAGQGSVSESSSSEESFSLQXNSINTDILLGSSNILEAGVLKSIVQNGTASGTAFLETNLEKQDEVPS

SEQ ID NO: 131890 - protein, 80 aa, Setaria italica
  Transcript Sequence Number=SeqID_65916
  Gene Ontology: Cellular component=cytoplasm; Biological process =intracellular protein transport
  Homolog annotation: Hit_ID=Q8RZ91; Match level="QueryCoverage=40%, HitCoverage=3%, E-value=9e-11, Identity=100%"; Hit description =Vacuolar protein sorting-associated protein VPS16-like
KLLTAPVLIGRLINANQHLLALRISEYLNLNPVTPYFFSLCFVIWKNCFIAGKHCAFAFHNKLRSTSCPLLGSKHYITLF

SEQ ID NO: 131891 - protein, 65 aa, Setaria italica
  Transcript Sequence Number=SeqID_65917
  Gene Ontology: Cellular component=cytoplasm; Biological process =intracellular protein transport
  Homolog annotation: Hit_ID=Q8RZ91; Match level="QueryCoverage=93%, HitCoverage=6%, E-value=3e-27, Identity=91%"; Hit description =Vacuolar protein sorting-associated protein VPS16-like
SQSTKQAIFMGSSVSDTIKTCIAMGNERAALKVKSEFKVPDKRWYWLKTCALATVGNWHASTKGL

SEQ ID NO: 131892 - protein, 148 aa, Setaria italica
  misc_feature (33)..(33): Xaa can be any naturally occurring amino acid
  misc_feature (107)..(107): Xaa can be any naturally occurring amino acid
  Transcript Sequence Number=SeqID_65918
  Gene Ontology: Mol. function=protein binding; Cellular component =cytoplasm; Biological process=intracellular protein transport
  Homolog annotation: Hit_ID=Q8RZ91; Match level="QueryCoverage=91%, HitCoverage=15%, E-value=2e-61, Identity=88%"; Hit description =Vacuolar protein sorting-associated protein VPS16-like
FGKSKFPIGLSLRGILLFFQQVRPIEQAHRLFXAETKEHVFESKASEEHAKLLRSQHELEVSTKQAIFMGSSVSDTIKTCIAMGNERAALKVKSEFKVPDKRWYWLXKHVLLATVGNWDALEKFSRERRPPGGYKPFVEACIDAGTKN

SEQ ID NO: 131893 - protein, 94 aa, Setaria italica
  Transcript Sequence Number=SeqID_65919
  Gene Ontology: Mol. function=transferase activity; Cellular component= membrane
  Homolog annotation: Hit_ID=B6T2U9; Match level="QueryCoverage=94%, HitCoverage=21%, E-value=6e-40, Identity=91%"; Hit description =Secondary cell wall-related glycosyltransferase family 47
YPLGWAPWSPRLVEAVVFGCIPVIIADDIVLPFADAIPWEEIGVFVEEKDVPKLDTILTSMPIDDILRKQRLLANPSMKQAMLFPQPAQTKGNR

SEQ ID NO: 131894 - protein, 109 aa, Setaria italica
  misc_feature (67)..(67): Xaa can be any naturally occurring amino acid
  Transcript Sequence Number=SeqID_65920
  Gene Ontology: Mol. function=transferase activity; Cellular component= membrane
  Homolog annotation: Hit_ID=B6T2U9; Match level="QueryCoverage=94%, HitCoverage=24%, E-value=3e-45, Identity=83%"; Hit description =Secondary cell wall-related glycosyltransferase family 47
SCTYFLLFVSVIDFGACFHYQEEKAIERGILPMLRRATLVQTFGQKNHVCLKEGSIIIPPYAPPQKXMQAHLIPPDTPRSIFVYFRGLFYDNGNDPEGGYYARGTRASL

SEQ ID NO: 131895 - protein, 95 aa, Setaria italica
  Transcript Sequence Number=SeqID_65921
  Gene Ontology: Mol. function=transferase activity; Cellular component= membrane
  Homolog annotation: Hit_ID=B6T2U9; Match level="QueryCoverage=94%, HitCoverage=21%, E-value=6e-43, Identity=87%"; Hit description =Secondary cell wall-related glycosyltransferase family 47
RFLLSSAVRTLKPEEADWFYAPVYTTCDLTPAGLPLPFKSPRMMRSAIQFISHKWPFWNKTDGADHFFVVPHDFGACFHYQEEKAIERGVSGGIK

SEQ ID NO: 131896 - protein, 79 aa, Setaria italica
  Transcript Sequence Number=SeqID_65922
  Gene Ontology: Mol. function=transferase activity; Cellular component= membrane
  Homolog annotation: Hit_ID=B6TD30; Match level="QueryCoverage=50%, HitCoverage=9%, E-value=5e-12, Identity=80%"; Hit description =Secondary cell wall-related glycosyltransferase family 47
MGSRTGWLPVALLLLAASALAPRVAAAAAAGGGGEAEHAVQQHSERISGSAGDVLEDNPVGRLKVFIYDLPRKYNKKMV

SEQ ID NO: 131897 - protein, 94 aa, Setaria italica
  misc_feature (70)..(70): Xaa can be any naturally occurring amino acid
  Transcript Sequence Number=SeqID_65923
  Gene Ontology: Mol. function=hydrolase activity, hydrolyzing O -glycosyl compounds; Cellular component=chloroplast; Biological process=carbohydrate metabolic process
  Homolog annotation: Hit_ID=Q41742; Match level="QueryCoverage=86%, HitCoverage=9%, E-value=3e-37, Identity=90%"; Hit description=Su1p (Fragment)
GNCRNSSLVLCRYFPTSEQLHWHGHQPGKPDWSEGSRFVAFSMKDETKGEIYVAFNTSHLPVVVGLPERXGFRWEPVVDTGKAAPYDFLADDLP

SEQ ID NO: 131898 - protein, 75 aa, Setaria italica
  Transcript Sequence Number=SeqID_65924
  Gene Ontology: Mol. function=hydrolase activity, hydrolyzing O -glycosyl compounds; Cellular component=chloroplast; Biological process=carbohydrate metabolic process
  Homolog annotation: Hit_ID=Q41742; Match level="QueryCoverage=89%, HitCoverage=8%, E-value=2e-34, Identity=100%"; Hit description=Su1p (Fragment)
YWGKILLILSWNCGEEGEFASLSVRRLRKRQMRNFFVCLMVSQGVPMFYMGDEYGHTKGGNNNTYCHDHYVNYFR

SEQ ID NO: 131899 - protein, 124 aa, Setaria italica
  Transcript Sequence Number=SeqID_65925
  Gene Ontology: Mol. function=aspartic-type endopeptidase activity; Biological process=proteolysis
  Homolog annotation: Hit_ID=B2CSI3; Match level="QueryCoverage=93%, HitCoverage=35%, E-value=5e-35, Identity=61%"; Hit description =Putative nucellin-like aspartic protease
QLNGASPRFVHDDSDKTLPFCMKADFSVRSVDDVKHFFKPLSLQFKKQFFFSRTFNIRPEDYLIVSDKGNVCLGVLDGTAIGYDSVIIVGDVSLRGKLIAYDNDENQLGWIDSDCTDPSEQSRI

SEQ ID NO: 131900 - protein, 56 aa, Setaria italica
  Transcript Sequence Number=SeqID_65926
  Gene Ontology: Mol. function=aspartic-type endopeptidase activity; Biological process=proteolysis
IYPSLLFLADVSLRGKLIAYDNDENQLGWIDSDCTDPSEQSRIPFFLRKVLHNQLL

SEQ ID NO: 131901 - protein, 86 aa, Setaria italica
  misc_feature (10)..(10): Xaa can be any naturally occurring amino acid
  Transcript Sequence Number=SeqID_65927
  Gene Ontology: Mol. function=aspartic-type endopeptidase activity; Biological process=proteolysis
  Homolog annotation: Hit_ID=B2CSI3; Match level="QueryCoverage=74%, HitCoverage=20%, E-value=1e-21, Identity=68%"; Hit description =Putative nucellin-like aspartic protease
DGVLGLGSRXISLPTQLASRGIISNVFGHCMTTDPSSGGYLFLGDDYIPRWGMTWVPVRNGPADISSKILPILVTLMEQPQRENIA

SEQ ID NO: 131902 - protein, 73 aa, Setaria italica
  Transcript Sequence Number=SeqID_65928
LHSFTRLHQNLDAELHVHKNRRGQTISGSMCVMFTKVGCAILSSGRKEFCFVRLGRCSLNQLGWIDSDCTDPS

SEQ ID NO: 131903 - protein, 54 aa, Setaria italica
  misc_feature (34)..(34): Xaa can be any naturally occurring amino acid
  Transcript Sequence Number=SeqID_65929
  Homolog annotation: Hit_ID=Q7XUX0; Match level="QueryCoverage=100%, HitCoverage=38%, E-value=2e-10, Identity=62%"; Hit description =OSJNBa0027P08.15 protein
IWYCIEQDREKDELPAHMTCVSEAEIRKAEKAEXREARDLKGTMRKRMEFLDFD

SEQ ID NO: 131904 - protein, 53 aa, Setaria italica
  Transcript Sequence Number=SeqID_65930
WMRSRALGRTEDPSLHETELLCNCINSCRLCSVDHDPLSFPLAGTAKGNDRGS

SEQ ID NO: 131905 - protein, 59 aa, Setaria italica
  Transcript Sequence Number=SeqID_65931
FHASIFAMLRCGLCIAQVLRLKLRYISSVSIDKTMRQHSSYCQWKLKLRYISSVSIDKT

SEQ ID NO: 131906 - protein, 115 aa, Setaria italica
  misc_feature (42)..(42): Xaa can be any naturally occurring amino acid
  Transcript Sequence Number=SeqID_65932
  Gene Ontology: Mol. function=hydrolase activity; Cellular component =membrane; Biological process=auxin mediated signaling pathway
  Homolog annotation: Hit_ID=B6SKJ2; Match level="QueryCoverage=87%, HitCoverage=24%, E-value=2e-40, Identity=80%"; Hit description =Nodulin-like protein
ILYAGIVNAHSWSPLVAVYLVIQAPVMIKYPASLSLTAYSYXFASIFMVLTGVLATNGLHEWALTKTEIIAILYAGIVASCMCYATMTWANKILGPSLVSLYNPLQPACSTILST

SEQ ID NO: 131907 - protein, 65 aa, Setaria italica
  Transcript Sequence Number=SeqID_65933
  Gene Ontology: Cellular component=membrane
  Homolog annotation: Hit_ID=B6SKJ2; Match level="QueryCoverage=72%, HitCoverage=11%, E-value=7e-10, Identity=68%"; Hit description =Nodulin-like protein
LTAYSYFFASIFMVLTGVLATNGLHEWALTKTEIIAILYAVSISICLIAKTASITCIMHRSDAKI

SEQ ID NO: 131908 - protein, 58 aa, Setaria italica
  misc_feature (37)..(37): Xaa can be any naturally occurring amino acid
  Transcript Sequence Number=SeqID_65934
  Gene Ontology: Cellular component=membrane
  Homolog annotation: Hit_ID=B6SKJ2; Match level="QueryCoverage=84%, HitCoverage=11%, E-value=2e-11, Identity=71%"; Hit description =Nodulin-like protein
DLGTCPGYLTKFLNYLHIQGIVASCMCYATMTWANKXLGPSLVSLYNPLQPACSTILS

SEQ ID NO: 131909 - protein, 65 aa, Setaria italica
  Transcript Sequence Number=SeqID_65935
YDLTYLEEYQTYLKRIAAATYEAADLIARGATNGEPPDLVAFLKEHWSQAAFAEGVSAGEAHFVN

SEQ ID NO: 131910 - protein, 68 aa, Setaria italica
  Transcript Sequence Number=SeqID_65936
DRQYFGISPSRTKIKDIYLMDLISAYYVLMIFIDQCFNTDGALGHWLGRKRLETSVSLAWGTMDTMSS

SEQ ID NO: 131911 - protein, 102 aa, Setaria italica
  misc_feature (1)..(34): Xaa can be any naturally occurring amino acid
  Transcript Sequence Number=SeqID_65937
XXXXXXXXXXXXXXXXXXXXXXXXXXXXXXXXXXLFDQGRFFIPESILTMVTKPISILDIHEKEKAWKTWDWIFSDLMLSRGSTGDGSGRSAIGNLLFGGHP

SEQ ID NO: 131912 - protein, 63 aa, Setaria italica
  Transcript Sequence Number=SeqID_65938
  Homolog annotation: Hit_ID=B6SVW9; Match level="QueryCoverage=77%, HitCoverage=11%, E-value=7e-12, Identity=68%"; Hit description=Tubby- like protein
RDCQEPEFLGRSLSCSLKQPGPRDGTIQCFIKRDKSTQIYYLYLCLSSSKFIAMWTMDFLIKD

SEQ ID NO: 131913 - protein, 86 aa, Setaria italica
  Transcript Sequence Number=SeqID_65939
  Gene Ontology: Cellular component=plasma membrane
  Homolog annotation: Hit_ID=B6TJQ5; Match level="QueryCoverage=96%, HitCoverage=18%, E-value=2e-30, Identity=79%"; Hit description=Tubby- like protein
MFISTAVLVENGKFLLSAKRNIRPTCTEYIISMNSGNVSRSTNTNTYIGKLRSNFLGTKFVIYDTQPPYNAASATQSGKTSQRFYS

SEQ ID NO: 131914 - protein, 42 aa, Setaria italica
  Transcript Sequence Number=SeqID_65940
LSAPKFSWGLHSAAGGGALLTQKQPQKCMGLGYLVFQQIILL

SEQ ID NO: 131915 - protein, 78 aa, Setaria italica
  Transcript Sequence Number=SeqID_65941
LRTGDTRRKTSKNFHGLIPELAAALMAICEVFGCLSPSVSWTLRTGEEISAHTVFSTAEDTQELAVSQLEHHLPLLLI

SEQ ID NO: 131916 - protein, 44 aa, Setaria italica
  Transcript Sequence Number=SeqID_65942
  Homolog annotation: Hit_ID=UPI0001A7B04F; Match level="QueryCoverage =93%, HitCoverage=3%, E-value=1e-10, Identity=80%"; Hit description =REF4 (REDUCED EPIDERMAL FLUORESCENCE 4)
MLLPFVVDAALTACSHGRLFPRELATGLKDLADFLPASLATIVS

SEQ ID NO: 131917 - protein, 37 aa, Setaria italica
  Transcript Sequence Number=SeqID_65943
DIEILIAQLHCDFFNIHPSTMRLFISCWVSTLALPQL

SEQ ID NO: 131918 - protein, 67 aa, Setaria italica
  Transcript Sequence Number=SeqID_65944
  Subcellular localization annotation: CTP_CleavageSite=41; ConfidenceScore=5.59e-01
NHVNSVSHTLPSQLAGWSSFMKGAPLTQSLVNMLASTPAPRCVSFSPLKRELCIICQAFELAFTRNP

SEQ ID NO: 131919 - protein, 60 aa, Setaria italica
  Transcript Sequence Number=SeqID_65945
  Gene Ontology: Cellular component=endoplasmic reticulum
  Homolog annotation: Hit_ID=B6SQ11; Match level="QueryCoverage=100%, HitCoverage=24%, E-value=2e-25, Identity=90%"; Hit description=Seed maturation protein
VIYIGFVCAHTLPVLYEKYEDQVDNFLYSLLGLLQDQYQKLDQGVLSKIPKGNLKAKKNE

SEQ ID NO: 131920 - protein, 128 aa, Setaria italica
  Transcript Sequence Number=SeqID_65946
  Gene Ontology: Cellular component=endoplasmic reticulum
  Homolog annotation: Hit_ID=B6SQ11; Match level="QueryCoverage=85%, HitCoverage=44%, E-value=1e-53, Identity=92%"; Hit description=Seed maturation protein
  Pfam annotation: Domain name=Reticulon; Domain location=1-121; Score =61.4; E_value=3.5e-15; Accession=PF02453.9; Description=Reticulon
FALVLGMVVQFVWSNFSNMLSGSPSQVPRVELPDELFVNIAVAIGAQINKFLSFLQDLSCERNLKHFVVAIAGLWAAAVIGSWCNFLTVIYIGFVCAHTLPVLYEKYEEPKYEQILPYLTKYLYFRLL

SEQ ID NO: 131921 - protein, 79 aa, Setaria italica
  Transcript Sequence Number=SeqID_65947
  Gene Ontology: Cellular component=endoplasmic reticulum
  Homolog annotation: Hit_ID=B6SQ11; Match level="QueryCoverage=78%, HitCoverage=25%, E-value=7e-24, Identity=85%"; Hit description=Seed maturation protein
RPSRQFPLQHWKCVSTNKSNIYNCQKTLHGALGGGKPADCLLWRNKKISSSVLAVATAIWVFFEWLDYHFLTIVSFALV

SEQ ID NO: 131922 - protein, 137 aa, Setaria italica
  Transcript Sequence Number=SeqID_65948
QDFSLSFSAPMVTILKWVCVCDFLDVGLNGLWKLYKIRECKQHGLQLDIHILDEPDMLEEAWSFAQMIAQLPVSVFSVMELDLKTGGHAFGPLVLHLLRIQPVIQSFKLVLARGKGGVPLSLVKFVPLCLFNFSFLF

SEQ ID NO: 131923 - protein, 80 aa, Setaria italica
  Transcript Sequence Number=SeqID_65949
RTIFFCPSSLGESEILMVNLLSTGADWSISSRKSTSFVFSLQAMNFYNLKIRQRDVFNSPVARLFTGAIYWARHSSLASC

SEQ ID NO: 131924 - protein, 100 aa, Setaria italica
  misc_feature (9)..(9): Xaa can be any naturally occurring amino acid
  Transcript Sequence Number=SeqID_65950
  Gene Ontology: Mol. function=peptidase activity; Cellular component =membrane; Biological process=signal peptide processing
  Homolog annotation: Hit_ID=Q9SSR2; Match level="QueryCoverage=91%, HitCoverage=50%, E-value=8e-41, Identity=85%"; Hit description =F6D8.18 protein
KDPIRTGEXVVFNVDGREIPIVHRVIKVHERQDTKEVDILTKGDNNFGDDRLLYAHGQLWLQQHHIMGRAVGYLPYVGWVTIIMTEKPFIKVWSFFWFIY

SEQ ID NO: 131925 - protein, 38 aa, Setaria italica
  Transcript Sequence Number=SeqID_65951
  Gene Ontology: Mol. function=peptidase activity; Cellular component =membrane; Biological process=signal peptide processing
  Homolog annotation: Hit_ID=Q9SSR2; Match level="QueryCoverage=100%, HitCoverage=21%, E-value=2e-11, Identity=89%"; Hit description =F6D8.18 protein
AVGYLPYVGWVTIIMTEKPFIKYLLIGALGLLVITSKE

SEQ ID NO: 131926 - protein, 64 aa, Setaria italica
  misc_feature (9)..(9): Xaa can be any naturally occurring amino acid
  Transcript Sequence Number=SeqID_65952
  Gene Ontology: Mol. function=peptidase activity; Cellular component =membrane; Biological process=signal peptide processing
  Homolog annotation: Hit_ID=Q9SSR2; Match level="QueryCoverage=100%, HitCoverage=35%, E-value=2e-12, Identity=62%"; Hit description =F6D8.18 protein
MGFVGDTVXESIRSMQIRQVLTQIISLGMIVTSALIIWKGLIVVTGSESPVVVVLSGSMEPGFK

SEQ ID NO: 131927 - protein, 53 aa, Setaria italica
  Transcript Sequence Number=SeqID_65953
LVVQQHRAVADRKALRESVLYFTVYQMRRFLCLFGGRLPSNWIARSHAASTFP

SEQ ID NO: 131928 - protein, 49 aa, Setaria italica
  Transcript Sequence Number=SeqID_65954
  Homolog annotation: Hit_ID=B6T2R4; Match level="QueryCoverage=75%, HitCoverage=9%, E-value=3e-12, Identity=94%"; Hit description=IQ calmodulin-binding motif family protein
MSYRAHLAHRSQVLRCLRDLAVAKAKLKEIRSFFYTIPHLLWMAPPSGR

SEQ ID NO: 131929 - protein, 31 aa, Setaria italica
  Transcript Sequence Number=SeqID_65955
YNFQGRAHPERSGFDGAWTKDPLKFDNSYFV

SEQ ID NO: 131930 - protein, 42 aa, Setaria italica
  Transcript Sequence Number=SeqID_65956
SRSWPGRRRGTRRTYTLLASMLLMFAVAMVVLMASSNHRKPL

SEQ ID NO: 131931 - protein, 78 aa, Setaria italica
  Transcript Sequence Number=SeqID_65957
  Gene Ontology: Mol. function=binding
  Homolog annotation: Hit_ID=B9RG44; Match level="QueryCoverage=84%, HitCoverage=16%, E-value=4e-14, Identity=60%"; Hit description=Sil1, putative
VISPILARTICNLGNSDPDKLREKAAELERLSADELLKRQMEIKELMEKLKMPSDADLMKIAIADLNNSSVSLEDRQR

SEQ ID NO: 131932 - protein, 72 aa, Setaria italica
  Transcript Sequence Number=SeqID_65958
NSSVIIGDDDARVVGEGGISAYICCIKDQAHLESRNDVKFYFENPFISVMLKRDGKLGVGQDGNRITKIVRN

SEQ ID NO: 131933 - protein, 85 aa, Setaria italica
  Transcript Sequence Number=SeqID_65959
RLAVLAAAGKPPGEAEEQVPAWAKPGADEPPPWEREGGAVQGQEAGQVPFYAYLLASAVTAIAAVRLLGNSSFSFAARDALRHSP

SEQ ID NO: 131934 - protein, 84 aa, Setaria italica
  Transcript Sequence Number=SeqID_65960
VGMGSGGGGGGGYDPGYGGMGSYGQSFFNISYARSQPPPPPVAKQVRIAPDDEHIHFHSDDDSDSEGGGHIKFSDEEPDPAQRP

SEQ ID NO: 131935 - protein, 65 aa, Setaria italica
  Transcript Sequence Number=SeqID_65961
  Gene Ontology: Cellular component=plasma membrane
  Homolog annotation: Hit_ID=Q6Z3H8; Match level="QueryCoverage=92%, HitCoverage=6%, E-value=6e-20, Identity=78%"; Hit description =Putative bzip-related transcription factor
LKMLDEKGAEADKLEATEIYIRKLSTKISIAIQVVNTISQKISKLRDEELWPQTCELIQGYAVLF

SEQ ID NO: 131936 - protein, 80 aa, Setaria italica
  Transcript Sequence Number=SeqID_65962
PYESTSGAVWPRCPRRKLKATLSRQLIHPPSPLSVHWHASTPNFQSTSAKSAEIHDIISLLPIDFRTQTTKVTIDKTTRS

SEQ ID NO: 131937 - protein, 111 aa, Setaria italica
  misc_feature (23)..(23): Xaa can be any naturally occurring amino acid
  Transcript Sequence Number=SeqID_65963
  Gene Ontology: Mol. function=pyridoxal phosphate binding; Cellular component=chromoplast; Biological process=cysteine biosynthetic process from serine
  Homolog annotation: Hit_ID=B8A367; Match level="QueryCoverage=67%, HitCoverage=18%, E-value=9e-37, Identity=96%"; Hit description =Cysteine synthase
SMSMERRVLLRAFGAELVLTDAXKGMKGALDKATEILDKTPNSYMLQQFDNPANPKVHYETTGPEIWEDSKGKVDIFIGEGIVNINLYPLEAAIKARPMPVFPLVASTKTL

SEQ ID NO: 131938 - protein, 66 aa, Setaria italica
  Transcript Sequence Number=SeqID_65964
VDIFIGGIGTGGTISGAGRFLKEKNPEIKISSDEAVETAKQLAVQEGLLVGISSGAAAAAAIKLQR

SEQ ID NO: 131939 - protein, 107 aa, Setaria italica
  misc_feature (13)..(13): Xaa can be any naturally occurring amino acid
  misc_feature (36)..(36): Xaa can be any naturally occurring amino acid
  misc_feature (101)..(101): Xaa can be any naturally occurring amino acid
  Transcript Sequence Number=SeqID_65965
  Homolog annotation: Hit_ID=B9RBN5; Match level="QueryCoverage=98%, HitCoverage=15%, E-value=2e-29, Identity=61%"; Hit description =Ankyrin repeat-containing protein, putative
  Pfam annotation: Domain name=Ank; Domain location=21-55; Score=22.7; E_value=0.0016; Accession=PF00023.22; Description=Ankyrin repeat
  Pfam annotation: Domain name=Ank; Domain location=56-99; Score=0.8; E_ value=28; Accession=PF00023.22; Description=Ankyrin repeat
  Pfam module annotation: Pfam domain module=Ank::Ank; Domain location =21-55::56-99
MQVVKYLLASFDXIINSTDNHGNTALHVAAYRGHQXPVVEALVTASPSTLSAINNAGDTFLHSAVAGFRTPGFRRLDHQLELMRYLIRERTTDIQKIINLXNDAGLT

SEQ ID NO: 131940 - protein, 95 aa, Setaria italica
  Transcript Sequence Number=SeqID_65966
  Homolog annotation: Hit_ID=A2Q3Z1; Match level="QueryCoverage=90%, HitCoverage=28%, E-value=5e-31, Identity=72%"; Hit description =Tac7077, putative
KSSTALNTAANFLVHEFFTTHYFQDGIQPIPGARDALQNLSSFCSLSVVTSRQDAIKSHTLDWIERYYPGLFEQIHFGNHFALEGQSRPKSEICR

SEQ ID NO: 131941 - protein, 33 aa, Setaria italica
  Transcript Sequence Number=SeqID_65967
RSFGAQVLIDDNPRYAMECANDGMRVLLFELIE

SEQ ID NO: 131942 - protein, 88 aa, Setaria italica
  Transcript Sequence Number=SeqID_65968
RLRGLACRHQHSFPRPAQETCTPRIRQIRFRHSPTEKKEEKRNKARCNRRRNRLPEHARSGFRDEDESKPPARGRRLGPSLSSVLTPF

SEQ ID NO: 131943 - protein, 69 aa, Setaria italica
  Transcript Sequence Number=SeqID_65969
QIICHGPFDVKWIISIRSDKLSKNTSKHTSGAAYTLRISLIKWYLWLRIGSKFNIWDPQRLIFHVVDTF

SEQ ID NO: 131944 - protein, 43 aa, Setaria italica
  Transcript Sequence Number=SeqID_65970
VYAAPEVYTLRISLIKWYLWLRIGSKFNIWDPQRLIFHVVDTF

SEQ ID NO: 131945 - protein, 149 aa, Setaria italica
  misc_feature (79)..(79): Xaa can be any naturally occurring amino acid
  Transcript Sequence Number=SeqID_65971
  Gene Ontology: Mol. function=ubiquitin thiolesterase activity; Cellular component=nucleus; Biological process=ubiquitin-dependent protein catabolic process
  Homolog annotation: Hit_ID=Q2R2A3; Match level="QueryCoverage=83%, HitCoverage=8%, E-value=1e-61, Identity=92%"; Hit description =Ubiquitin carboxyl-terminal hydrolase family protein, expressed
LRKKFRLVFPSISSKSSLSFLLHFKEEVAKEYGIPVQFQRFWLWAKRQNHTYRPNRPLTAHEEAQSVGQLREVSNKAHXAELKLFLEVELGPELRPIRPPEKSKEDILLFFKLYDAEKEELRFVGRLFVKALGKPSEILTKLNEMAGFS

SEQ ID NO: 131946 - protein, 147 aa, Setaria italica
  Transcript Sequence Number=SeqID_65972
  Gene Ontology: Mol. function=ubiquitin thiolesterase activity; Cellular component=nucleus; Biological process=ubiquitin-dependent protein catabolic process
  Homolog annotation: Hit_ID=Q2QD24; Match level="QueryCoverage=97%, HitCoverage=40%, E-value=6e-74, Identity=91%"; Hit description =Putative ubiquitin protease (Fragment)
NDQYWTLRAEEIPEEEKNLGPHDRLIHVYHFMKDPNQNQQIQNFWRSFFWMVIREGETAAEVMERIQRKLRVPDEEFSKWKLAFISMNRPEYLQDTDVVSARFQRRDVYGAWEQYLGLEHTDTTSKRSYTANQNRHTYEKPVKNLIN

SEQ ID NO: 131947 - protein, 121 aa, Setaria italica
  Transcript Sequence Number=SeqID_65973
  Gene Ontology: Mol. function=ubiquitin thiolesterase activity; Cellular component=nucleus; Biological process=ubiquitin-dependent protein catabolic process
  Homolog annotation: Hit_ID=Q2R2A3; Match level="QueryCoverage=100%, HitCoverage=8%, E-value=2e-48, Identity=80%"; Hit description =Ubiquitin carboxyl-terminal hydrolase family protein, expressed
LLRYKFDDERVTKEDAKKALEEQYGGEEELPQVNPGFNNAPFKFTKYSNAYMLVYIRESDKEKIMCTVDEKDIAEHLRVRLKKEQEDKEHKKKEKAEAHLYTIIKVARDEDLKQQIGKDIY

SEQ ID NO: 131948 - protein, 134 aa, Setaria italica
  misc_feature (24)..(24): Xaa can be any naturally occurring amino acid
  misc_feature (75)..(75): Xaa can be any naturally occurring amino acid
  Transcript Sequence Number=SeqID_65974
  Gene Ontology: Mol. function=ubiquitin thiolesterase activity; Cellular component=nucleus; Biological process=ubiquitin-dependent protein catabolic process
  Homolog annotation: Hit_ID=Q2QQM3; Match level="QueryCoverage=96%, HitCoverage=11%, E-value=1e-48, Identity=75%"; Hit description =Ubiquitin-specific protease 12, putative, expressed
PNVMCEILTRTYFRSSQLEDGDIXCFQKAPRADHDTQVRYPDVPSFLEYVHNRQYLFGAGCAFPALEKPKDDDFXLELSKLHTYDDVVERVACQLELDDPAKIRLTSHNCYSQQPKPQPVKYRGVGSLFLFGTI
